United States Patent Application Publication US 2024/0382605 A1 - sequence listing, part 2

SEQ ID NO: 253 - DNA, 60349 bp, Homo sapiens
  source 1..60349: mol_type = genomic DNA
agcttcaggcggctgcgacgagccctcaggcgaacctctcggctttcccgcgcggcgccgcctcttgctgcgcctccgcctcctcctctgctccgccaccggcttcctcctcctgagcagtcagcccgcgcgccggccggctccgttatggcgacccgcagccctggcgtcgtggtgagcagctcggcctgccggccctggccggttcaggcccacgcggcaggtggcggccgggccctgaggcgcgggatccgcagtgcgggctcgggcggccgggcccagggaaccccgcaggcgggggcggccagtttcccgggttcggctttacgtcacgcgagggcggcagggaggacggaatggcggggtttggggtgggtccctcctcgggggagccctgggaaaagaggactgcgtgtgggaagagaaggtggaaatggcgttttggttgacatgtgccgcctgcgagcgtgctgcggggaggggccgagggcagattcgggaatgatggcgcggggtgggggcgtgggggctttctcgggagaggcccttccctggaagtttggggtgcgatggtgaggttctcggggcacctctggaggggcctcggcacggaaagcgaccacctgggagggcgtgtggggaccaggttttgcctttagttttgcacacactgtagttcatctttatggagatgctcatggcctcattgaagccccactacagctctggtagcggtaaccatgcgtatttgacacacgaaggaactagggaaaaggcattaggtcatttcaagccgaaattcacatgtgctagaatccagattccatgctgaccgatgccccaggatatagaaaatgagaatctggtccttaccttcaagaacattcttaaccgtaatcagcctctggtatcttagctccaccctcactggttttttcttgtttgttgaaccggccaagctgctggcctccctcctcaaccgttctgatcatgcttgctaaaatagtcaaaaccccggccagttaaatatgctttagcctgctttattatgattatttttgttgttttggcaatgacctggttacctgttgtttctcccactaaaactttttaagggcaggaatcaccgccgtaactctagcacttagcacagtacttggcttgtaagaggtcctcgatgatggtttgttgaatgaatacattaaataattaaccacttgaaccctaagaaagaagcgattctatttcatattaggcattgtaatgacttaaggtaaagagcagtgctattaacggagtctaactgggaatccagcttgtttgggctatttactagttgtgtggctgtgggcaacttacttcacctctctgggcttaagtcattttatgtatatctgaggtgctggctacctcttggagttattgagaggattataagacagtctatgtgaatcagcaacccttgcatggcccctggcggggaacagtaataatagccatcatcatgtttacttacatagtcctaattagtcttcaaaacagccctgtagcaatggtatgattattaccattttacagatgaggaacctttgaagcctcagagaggctaacagacataccctaggtcatacagttattaagagaaggagctctgtctcgaacctagctctctctctctcgagtaataccagttaaaaaataggctacaaataggtactcaaaaaaatggtagtggctgttgtttttattcagttgctgaggaaaaaatgttgatttttcatctctaaacatcaacttacttaattctgccaatttcttttttttgagacagggtctcactctgtcacctaggatggagtgcagtggcacaatcactgctcactgcagcctcgacttcccgggctcgggtgattctccccaggctcaggggattctcccacttcagcctcccaagtagctgggactacaggtgcgcaccaccatccctggctaatatttgtactttattttatttatttatttatttattttttgagatggagtttcgctcttgttgcccgggctggagtacagtggcatgatctcggctcagtgcaacctctgcctcccgggttcaagcgattctcctacctcatccccctgagtagctgggattacaggcgcctgccaccatgcctggctaattttttgtatttttaatagagacgaggtttcaccatgttggccaggctactctcgaactcctgatctcaggtgatccacccgccttggcctcccaaagtgctgggattacaggcgtgagccactgcgcccggcctaatatttgtattttttgtagagatggtgttttgccatgttgtccaggctggtcttgaactcctgagctcaagcgatctgcccgcctctgcttcccaaagtgctgggattacaggcatgagccaccgtgcctggcctaggtagacgcttttagctttggggtgtgatgcctgccccagtatatagtgaatttaattattgctagagctggctgtttgttagttttctttgaacataagatactcattgtttttagtttgcaaatccctcttcctttttaaaaaatttctttcccttaaattgtttgcatgttagcaataacaaatgcttaaatggtgctatgtgctagatactcttctaagccctgttatgtatattaactaattttttaaattacacaaatcagagaggttaagtaacttgcccaagattacccaacaatactaggatttgaacctaagtttgtctcaccccagattctgctcttaatctctaaacttttaagttagtagtgacaatagtaggtatttattgaatacttaactatgttttaggcgttgaagtaaatattttgcaggcattatctaatgtaaacaccctaaagttacataacaggtaccctttaggtaaataaacactagtatgaccttggaggcacagatagttgaagtaacttgcccaatatcacttacatgaaattggccctcaaatgtgtctgatacaacccatgctgcttgtaactatcgttttaaactgccagggtaaacttggacacacttgagctaagaaaaagcttttagatttttgcaaattaatgtgaaagatatgctttatgtggatataatatcttctaaatttcggggatggtagtcctagaaatgtaatcctgccctagccgagcttaccctgccaataattttttacagaattggtaaaacggagcaccttttttttgtccttggccacactgttatcaacagggtgtagattgacatcaatctgtaggtgtaaaccagaattactctttgtgaccaccaggaaatagagcagttcagttcaggggtttctttctgtgaatttagcactgtgacctgcatactacaagtctactttgttttctatccattgtttgtatctgggtattgcaaaaggtaggaaaaggaccaaccagatcagcagagaagagttgccttggagttttcttttagttttctgcagttcattagatagtaactaggccatgtcattttactcccttgtagtgaagatatgttgaagttgtactggtatactcttctacctttctgtaattttatattgtgtagacttgataaaatttatgtgtcaatcaccaccattaatatcaatattgagcctcaattcttatttttctgcccagtggctgccaaattactaacatttacaataattcactactactaagataatctactagttcgatcacatacttcaaattgttatggaactactgtcttcagcattgtgcttctgataactgataagtataattttttttttgtccagagtgaacatgtctattcttccactgtacacactaataaaaggaaaaattgtaatattgggtaaattcatgtccttacacatgtagtagttatgagcccatgtccctagaatgagtaataatttatccctcccttggttgaatagtcaagaatgctgattttaattcttctaacagctttatccctcagaagggaaggcaagcaagttatatatgtagtttatttgtaagactgatatgaaattggaagatgaatctactattagctttaattatttttacatttaggaatattgcatcagtaactcataattttggttttctgttatcctgagttaacacaaattatccaaggagatggcggatcatctgctttgaggtgtttttttttgagaattttaatgtatctgaatataaaaggtaaaaatatgccaactagcaatttctgcccattccagaagtttggaaatattactcattactaggaattaaataaaatatggtttatctattgttatacctcttttaattcacatagctcatttttatcttttatttttgtttgttttttttgagatggagtcttgctctgtcaccaggcaggagtgcagtgatgcaatctcggctcactctagccaccgactccctggttcaagcgattctcctgcctgagccttctgagtagctgggattacaggcaggcaccaccacgcccagctaatttttgtagagacaggatttcaccgtgttggccaggatggtctccatctcctgacctcatgatctgcctgcttcggcctcccaaagtgctgggattacaggtgggagccactacgcctggcccacatagctcatttttagactcacttccattaagtcttgtttggacccacgaacattgtctttttttttttaagatggagtttcacttttgttgcccagactgtagtgcaatggtgcaatctcagctcactgcaatctctgcctcctgggttctagcaattctcctgcctcagcctcccgagtagctggaattacaggcgcccgccaccacgcccagctaatttttgtgtttttagtagagacggggtttcaccatgttgggcaggccaggggtgatccgcccacctcagcctcccaaagtgctgggattacaggtgtgagccaccgcatctggccaacatgtcttttttttttttttcctttttaaccacaaagagacttaagcagtccttgtcacagatgatgaattgatgttgcaagtattgtcttagcttggattaattttcttgcttactgtaattttagataatatagctttgtaattagagattttatgtgtaaaccacaaaaatgtttacatgaaggccattattacagatgtgacgtgcataattattagtaatttgtatgtttacatgggtcagtctggcaaaaaattatgaagttttaaaaattaaaaaaaattataatgccagttttactggaaagtaaaattatttcagtaatcgattatagcaaaagtattgattttcattccagacaaaagtcagaatgaaaggtaatttctcaatactctttcagattaataaaagtacctgtagcgatttttatcattcacaagtatatcacaagtaagttagaatttgagaactgtgttctagatctctgaggagatgcagtcagatttctgaactgtctcagcaaatggtaagtaacttagagctagtaattaataacctgtcctttgatttctgattcagccaagaatggccatatttgggaaaggcagatctggagagtaaccacgttttcattcatttaccacttctaggcccctccagagctctcagatattttggggttgagcccttccccaaagccatacaggaccttttttttgtgatctgttctagccatttttatgttgggtgcttgttatggactgagcatttatgtcctcccacaccccccccataccttttttgaagtcctaacccccagtgtgatggtatttggagacagggcctttggaaggtaattacagttagaagaagtcgggagggttgggcccaggtctgattggattagtgcccttatatgaaaagacaccaggacgggcgcagtggctcacacctgtaatcccagcactttgggaggccaaggtgggtggatcacgaggtcaggagtttgagaccagcctggccaatgtagtgaaacaccatctctactaaaaatacaaaaattagctgggtgtggtagcgggctcctgtcatccaagctactcgggagggtgaggcatgagaatcacttgaacccgggagttggaggttgcagtgagcccagattgtgccactgtactccagcctgggtgacagagtgagactctgtctcaaaaaagaaaaaaaaaaaaaaagagacaccagagagcttgttagaagaggtcatgtgagcacacagttagaagaccttcaagccaaagaagaggcctgagattgaaacctaccttgcaggtaccttaattttggacttcccagcctccaaaactgtgagaaataagtttctgttaagtcactcagtctgtggtattttgttatggcagcctgagcaggtagttgttctttcagaaggtgttgataataaccacatgcaacaccaagtcacaaataataaaacagatgtaacttatattcatacagaaagttgggcactgccattgccttgttggtttacacggctgtgctagttcagtagcagaaaggtgctggtctcctttactcagtttacaatctaggcagtagaatgtaatcactgctttaaacttgatactgcttagggagagaatcattggtgctgggtaactttgggttctaggtttactttttgtgtatatataactgtttttggtaaatcacaagtttctgggcttgtcgaattagattttgttacagattatgagctttattatgctatacagttagttgtatgtatatatgcctttcccactagattttaagctttttttttttttttttttttgtgacggagtcttgctcttgtcgcccaggctgaagtggagtgcagtggcacaatctcggctcactgcagcctccacctcctaggttcaagcgattctcctgcctcggcctcccaagtaactgggactacaggcacgtgccaccacacccggctaatttttgtattttttgtagagacagggtttcgccatgttggctaggctggtcttgaacttctggcctcaggtgatccacccgcctcagcctcccaaagtgctgggatttacaggcatgagccaccacgcccagctataagctctttaagggttgtaaatttataatcattcttttactctcctgcaaattctgttgcacactgccttaatcaaggtagatgctgaatgcatttttgtataattgaatatgttgcaatccccaactctctccaactgttcctgtcaaagcagccactggattgttaactaatccatattagatggggttaattaatatcagatgggacaagtaagggctaataagattataggccaccaagtagatttctgtctagctcttatagagattgagtttattggacctgtttgataggaagttttggtgtttgggatgattaaaactgaagttcctatttattgaattatacctatttatattatttcatatcagtggtccacatgcaagtgaggcttctgagacagagtttgagttctctcttcaactaccataacacttaacctgtatctttttttttttttttttttttagacggagtctcgctctgtcactcaggctggagtgtagtggtatgatctcggctcactgtaacctctgcctcctggattcaagcagttctccatgtctcagcctccctagtagctgggattacaggcctgtgccaccatgcctggctaattttttttttgtatttttagtagagacggggttttaccacgttggccaggctggtctcgaactcttgacctcgagcgatcaacttgccttggcctcccaaagtgctgggattacaggcatgagccacagcgcccagccgtctttttttttaaatagcaatttaacactgttcacagttactcatgtacatgtcatgccatctattacactgtaagttctgtgagggtagctgtatcaaatttatctaactctctctagtatgcatgacatagtaagtattcaataaatatttgcatattagtgataaggatacaggttctgaatagtgggtccttaccatttaagaattagtatttgatggccgggcggggtggctcacgcctgtaatcccagcactttgggaggctgaggcgggcggatcatgagatcaggagatcgagaccatcctggctaacatggtgaaatcccgtctttacaaaaaaaatacaaaagaattaaccaagtgtggtggtgggtgcctgtagtcccagctactgctttgtgaggctgaggcaggcagatcacctgaggtgggaaattcaagaccagcctgaccaacatggagaaaccccatctctactaaaaatacaaaattagccgggcgtggtggcgcatgtctgtaatcccagctactcgggaggctgaggcaggagaatggcgtgaacccgggaggcggagcttgcagtgagccaggatcgcgccactgcactccagcctgggcgacagagcgagactccgtctcaaaaaaaaaaaaaaaaaaaaaattagtatttgatatttgatcattaaatatgaattaagaggacttagactttttgttaaatgtcaagctgggaaaagttgtcatttaaatgaattgcctcttatttaatttcgtctgatgatacattttgtttttattttgtaaaaaattattttttttctttttggagacagggtcttgctctgttgcccaggctggtcacaaactcctgacctcaagcaatcctcctgccttagcctcccaaaatgctgggattacaggcgtgagccacctcgcccggccttgtattatgatacattttgaacaactacaagtagacttggtataatgaacctgcacgtacccattgccaagttctgacaactgtctgtctatagccaattatgcatttcttaaattagaacccccccaatatacccaaatatatatatatgtgtgcatatatatagtaagttgtaacaaagttgtgaattcatacctgaagtatctcaagtgatgcaagttttatgaatttttgtttatgccttttgggaagagttgtattgacaaattttttatgcttaaagtaaaccataaatcaaaaaaataaaatctaggatgcaataaaacaaaacaacttcttgacataagtatggtatgtaaatctgttttgattggaaatcaatttgttatattgccagaattcctgttttagaatacatctctgctgatctgtctgtattcttagactgcatatctgggatgaactctgggcagaattcacatgggcttcctttgaaataaacaagacttttcaaattcttagtcgatctgcagaacctgtagccaggcactgaaccattttgatagatgcagtaatcgttgcaagtgtatatttcaaggagttctggctgggtcctagtttatgcttgtggcagaagcagtgagtaactgggaggaagttggtgagtaagcttcaaggaagaagtcatttttagtactctggatcttcctgattttaaagcactacaaaatggtgcattttcattcttgtcaagtgataacagatatattctgatgagcctgaaatgaatatatattgtatcatttttataatatctagcaaggtttgtattttcctagaacttgaactaaatttcagttcataaaatttataaaatacttagttgttgtaaaatatttttggaatgttcacataggtgacacacaaatgtcccattttcattctttctatagtaaatatgttctgatatgtgaaggtttagcagatgcatcagcatttaatcctagaggatctggcataatcttttcccccaagaatagaaattttttctgcttatgaaagtagtacatgtttctttaaaaacaaatcaatattgacttctgcctgctgtatagcactatgcctccacctggccatgaccaggggcatgtcctggtccacctacctgaaaatgtttgcaaccagcctcctggccatgtgcacaggggctgaagttgtcccacaggtattacgggccaacctgacaatacatgaagttccaccaaagtctgagaactcagaactgagctttggggactgaaagacagcacaaacctcaaatttctcagcactggaaacctcaaaatataactgaattccataaataagattttaagtcttaaatatgtatttttaaatgtattaaaagtcaagctgcttgtatttaagcacctaatacaatgcttaggttgtaaaaggagatgctcaataggtactaactgatatattgagatttaattatggtttgaccaatatttattggaaaccgccaaagcttaaatcatcagcttcttgaatgtgatttgaaaggtaatttagtattgaatagcatgtgagctagagtatttcattctttctggtttatttcttcaaatagactttgaatataatggtgaatgggtattataaattaactaataaaaatgacattgaaaatgaaaaaatatatatattaaagtgtagaaagtgaccaggcgtggtggctcacacctgtaatccaagcaccttgggaggctgaggcaggaggatctcttgatcccaggagttcaagaccagcctgggcaacatagcgagacttcgtctctaaaaaaaaaaaagagagagaaaaaaattttttttatttaaaaaaagtgtagaaagtgtcaagaccccacttcttaccattatttggtatatttctctatacccacccacccttcctccttactccctccctcccttcccaatctttttatctttttgtattctgattttttgtttgtatattttgctttaatttaatgtatcctttaaaaatttcccatacattttatatgtatatataaaaacgcatgctgccaaagataatttataagaaagaccattgaatttttttaaaagtgatatatattcattgaaaaaaatttagaatatatagcaaagcaataaagaactaaataaaattgctgtaactcctctttcaaagataagtgcttttatgattttgttgtatttttttctgtatataggtacatatatagtatttataaagctgtactcatagtacattttcacatcacaggtaccatatcagtgttattaaatattttgtatgccaggggctagacataccaagacaaccaatatgtggttctacttaaataatattagagtatcttttatgatgacacttcatgagttgactataataatcttagacttctaagagtttgggttttcaaaagatcacttagcttttttgggtgatttttcccccttactgtgagatgagagaggctgtttggatttgggattggggtagcggggacagcaacttttcttttctttttcttttttattttgaggtagggtattgctgtgtcacccaggctggagtgcagtggtgtgatctcggctcactgcaacctccacctcccgggctcaggtgatcctcctgcttcagcctccccagtaactgggactacaggcgcgtgccacatgcctggctaattttgtatttttagtagagatggggtttcaccatgttggccaggctggtctctaactcctgacctcaggtgatacgcccacctgggcctcccaaaatactgggattacaggcatgagccgctgcatcagccagcagtttttcttgtggttttttttgtttgttttgttttgttttgtttttgagatagggtcttactctgttgtccacgctggagtgctgtggtatgatcgtagctcactgcagcctcaaactcctgggctcaagtgattccttctgcctccgcctcccgagtagctgggactacaggtatgcaccaccatacctggcaaatttttacaaagttttttgtagggacggggtcttgctacattccccatgtcggtcttgaactcctggcctcaagcaactctcctgtctcagcctcccaaagcactgggattacaagtgtgagccaccacaccatgccagtttttcctgttcagtgtgatattttatcttgttagactacagtgtgttaaaacttgttttactaaattttcaaacatactcaaaagtggagagaatagtataatgaatacccgtatgttcatcacccatgtttagaatattattaaatataaagattttgctgcgtttgtcttagctctttaaaatttttctttttctctttgtgacctaaaggaaattccatatcttatcactttacttctacattcttgactaagatgactaagacatatagttacatggttttttgttttgttttttgttttttaaagacgaaatctcgctcttgtcccccaggctggagtgcaatggtgccatctcagctcagtgcaacctctgccttctgggtacaagcgattctcctgcctcagcctcccaagtagctgggattacaggctcctgccaccacgcctggctaatttttgtatttttagtagagacggcggggggaggtttcaccatgttgacaaggctggtctggaactcctgacctcaggtgatccacccgcctcggcctcccaaagtgctgggattacaggcgtgagccaccgcgcccagcctgtttttttgtttgtttgttttgttttttttgagacagagtcttgctctgtttcccaggctggagtgaagtggcgcattcttggctcactgcaaccttcacctcccaggttcaagtgattctcctgcctcagcctcccaagtagctgggactacaggcatgtgtcaccacacccggctaatttttttgtatttttagtagagacgggatttcaccgtgttgcccaggctggtctcgaactcctgagctcaggcagtctgcctgcctcagcctcccaaagtgctgggattacacgtgtgaaccaacccgcccggcctgttgttttcttacataattcattatcatacctacaaagttaacagttactaatatcatcttacacctaaatttctctgatagactaaggttattttttaacatcttaatccaatcaaatgtttgtatcctgtaatgctctcattgaaacagctatatttctttttcagattagtgatgatgaaccaggttatgaccttgatttattttgcatacctaatcattatgctgaggatttggaaagggtgtttattcctcatggactaattatggacaggtaagtaagatcttaaaatgaggttttttactttttcttgtgttaatttcaaacatcagcagctgttctgagtacttgctatttgaacataaactaggccaacttattaaataactgatgctttctaaaatcttctttattaaaaataaaagaggagggccttactaattacttagtatcagttgtggtatagtgggactctgtagggaccagaacaaagtaaacattgaagggagatggaagaaggaactctagccagagtcttgcatttctcagtcctaaacagggtaatggactggggctgaatcacatgaaggcaaggtcagatttttattattatgcacatctagcttgaaaattttctgttaagtcaattacagtgaaaaaccttacctggtattgaatgcttgcattgtatgtctggctattctgtgtttttattttaaaattataatatcaaaatatttgtgttataaaatattctaactatggaggccataaacaagaagactaaagttctctcctttcagccttctgtacacatttcttctcaagcactggctatgcatgtatactatatgcaaaagtacatatatacatttatattttaacgtatgagtatagttttaaatgttattggacacttttaatattagtgtgtctagagctatctaatatattttaaaggttgcatagcattctgtcttatggagataccataactgatttaaccagtccactattgatagacactattttgttcttaccgactgtactagaagaaacattcttttacatgtttggtacttgttcagctttattcaagtggaatttctgggtcaaggggaaagagtttattgaatattttggtattgccaaattttcctctaagaagttgaatcattttatactcctgatgttatatgagagtacctttctcttcacaatttgtctcttttttttttttttttgagacaaggtctctgttgcccaggctggggtgcagtgcagcagaatgatcacagttcactgcagtctcaacctcctgggttcaagcgatccttccacctcagcctcctgagtagctgggactataggtgtgcgccaccactcccagctaatatttttattttgtagaaacagggttcgccatgttacccagcctcccaaagtgctgggattacaggcatgagccactggcccagtttctacagtctctcttaatattgtatattatccaagaaatttcatttaatcagaacctgccagtctgataggtgaaaatggtatcttgtttttatttgcatttaaaaaaaattatgatagtggtatgcttggtttttttgaaggtatcaaattttttaccttatgaaacatgagggcaaaggatgtgttacgtggaagatttaaaaaaaatttttaatgcatttttttgagacaaggtcttgctctattgtccaggctggagtgcagtggcacaatcacagttcactccagcctcaacatcctgcactaaagtgattttcccacctcacctctcaagtagctgggactacaggtacatgctaccatgcctggctaatttttttttttttgcaggcatggggtctcactatattgcccaggttggtgtggaagtttaatgactaagaggtgtttgttataaagtttaatgtatgaaactttctattaaattcctgattttatttctgtaggactgaacgtcttgctcgagatgtgatgaaggagatgggaggccatcacattgtagccctctgtgtgctcaaggggggctataaattctttgctgacctgctggattacatcaaagcactgaatagaaatagtgatagatccattcctatgactgtagattttatcagactgaagagctattgtgtgagtatatttaatatatgattctttttagtggcaacagtaggttttcttatattttctttgaatctctgcaaaccatacttgctttcatttcacttggttacagtgagatttttctaacatattcactagtactttacatcaaagccaatactgtttttttaaaactagtcaccttggaggatatatacttattttacaggtgtgtgtggttttttaaataaactccttttaggaattgctgttgggacttgggatacttttttcactatacatactggtgacagataccctctcttgagctacatcggtttgtggggagtcaaaagtcctttggagctaggtttgacaaataaggtgggttaacacttgtttcctagaaagcacatggagagctagagtattggcgaattgaagaaatccccctttttttttaacacacttaagaaaggggactgcaggtatactcaagagagtaagtcgcaccagaaaccacttttgatccacagtctgcctgtgtcacacaattgaaatgcatcacaacattgacactgtggatgaaacaaaatcagtgtgaattttagtagtgaatttcattcataatttgatcgtgcaaacgtttgatttttattactttagactattgtttctgattttatgttgggttggtatttcctgtgagttactgttttcctttaaaataggaatttttcatactcttcaaagattagaacaaatgtccagtttttgctgtttcatgaatgagtcctgtccatctttgtagaaactcgccttatgttcacatttttattgagaataagaccacttatctacatttaactatcaacctcatcctctccattaatcatctattttagtgacccaagtttttgaccttttccatgtttacatcaatcctgtaggtgattgggcagccatttaagtattattatagacattttcactatcccattaaaaccctttatgcccatacatcataacactacttcctacccataagctccttttaacttgttaaagtcttgcttgaattaaagacttgtttaaacacaaaatttagacttttactcaacaaaagtgattgattgattgattgattgattgatggtttacagtaggacttcattctagtcattatagctgctggcagtataactggccagcctttaatacattgctgcttagagtcaaagcatgtacttagagttggtatgatttatctttttggtcttctatagcctccttccccatccccatcagtcttaatcagtcttgttacgttatgactaatctttggggatttgtgcagaatgttattttagataagcaaaaacgagcaaaataggggagtttaactttaatattttcttttaaaaagcatttcatgttataagatcaattctgagtggtagaaatgctttgacattttatttccattttctacttttagtttttttcctatttgtttaagatcttagaggattattaagctgaactcctcaactgataaaaagcatgacatcttaaacataagcaaagcatatttttaggttaattttcacatagaaaacagtttattttatgtgaaattctatgtagatatactatttttttggtatttattgatatgtttattttattttattttattttattttattttattttattttatttatttatttttttttttgagacagagtctcactctgttgcccaggctggagtgcagtggcatgatcgtagctcactgcaacctccacctcccgggttcaagcaattcttctgtctcagcctcccgagtagctgggactacaggtgcctgccactatgcccggctaatttttgtgtttttagtagagatggggtttcaccttgttggtcaggctggtctcgaacccctgacctcaggtgatccacccacctcagcctcccaaagtgctgggattataggcatgagccaccgtgcccggccgacatgttaattttttaaaaaaggctttactggggtatattttatataatataataatcacatgttttaactatacaattccaagctttttagtatatttatagggctatgcaaggaagatatactgttaaacagtagaaattgagaaagctcttctgataatatctcttgatttgatgatggctcatgcctgtaatctcagtgctttggaaggccaagacagcagaatcacttgaggccaggggttcgagaccagcctgggcaacacagcaataccctatctttacaaataataaaaatatctgttgatttgaagtaaagtttttttttaaagacaaggtctcattctgtcacccaggctggaatgcagtagcaagatcacagctcactgtggccttgaccttctgggctcaagtgattctcccacttcggcctcccgagtagctgggactaacaggtgtgcaccaccatggctggctaatttttttttatgtttgtagagattgggtcttactgtgttgcccaggctgatcccgaactcctgggctcaagcagtcttcctgcctcagcctctaaaattgctgggattacaggcttgagtcaccatgcccagcctgaagtagcatttctaccctgtttaataattcagcagcttgtcatgtaagatattcatatatgcatataaaacattaggcagcttaatttggtaaaactgtaaaatggaaattttaaattgtttgcagcatcaataacattgatgtcagtatgatttttacatgctgatcttgaccaatttgaaacagtgagttaaaatctggctgatccgtactaatcctaaagaaatattctatgaactattaaatgtttccagaatatataaagaaacattatgatgtcaacacacccatctatttttttttggaaataaaaactccatttttcttattaaagaaaacatgcttattagaaaacatacggctgggtgcagtggcacacatgtaattccagtgctttgggagatcgaggtgggagaatcacttgaggccaggagtttgagaccagcctagacaacataatgagaccccctctctacacaaaaagaattagttgtgcatggtggcgtgcacctgtagtcccagctacttgggaggcagaggcaggagcatcccttgagcctaggagtttgagactgcaggagttcgagactgagtggaatgcagtggaactgcattccagcctgagtgacagagggagaccctgtcttaaaaaaataagaaagaaaacacaactgcagaaaattataaaggatttaagtcattccaaatatcactgccactttttatttagaatattctaaagaattctctctctgtgtacacacacacatatgcgtactcttaatccaagtagcttggtaggattttatttacctagtgcctagatgggaaattgcctggggattccaaatacctatttcattaaattaaagatgtcactgattttaagacttaacactatttttcatactgccaagaaagaaaacactaccagttataaatgtaaattgccatcaattgtaatacatcaattttagagctattattaataaaatgtgaatgtgcatcttagagcaatgaaatatagtactatatatttgatgaccttttctgccctgtgatattcagaaagtgaaagttaaatatgggctgagcatggtggctcacacctgtaatcccagtactttgggaagtcaagacgggaggctggcttgaacccaggagttcaagaccagcctaggcaatgtagcgagacgccatctcaaaatattaaaaataagtaaataagtaaataaaaagaaggttaagtatacaaatgtatttcctttgttgtgaatttatttcaattttatagtgattttttttttttgagacgaagtctcactcttgtcccccaggctggagtgcgatggcgtgatctcagctcactgcaacctctgcctcccaggttcaagctatactcctgccttggccccccgagtagctgggattacaggcgcctgctaccatgcctggctaatttttgtatttttagttgagatggggtttcaccatgttggccaggctggtctagaactcttgacctctggtgatccacccgcctcggactcccaaaatgctgggattacaggcgtgagccaccgtgcctggccagtggttttttgttgttgttgttgttgttgttttgtttttgtttttgtttttgttttgagacaggatcttgctctgtcacccaggctggagtgcagtggtgccatcttggttcactgcaacctctgcgtgggctcaagcaatcctcccacctccctttccagagtagcggggaccacaggtgtgtgccaccacacctgactaatttttgcatttttttttgtagaaacagggttttgccatgttgcccaggttggtctgaaactcctgagctcaaacaatccaactgccttggcttccctaagtgaaattacaggcatgggccactgtacccagtctagtgatttttttatttttatttttattttattttattttatttttttaccaaaaaaacaacaaagcctcaggaggaaaagttgatacacaagtaaattttattggaaatgtttttgtgtggaccttaagcagagggaaaattagtctgcattatggtgtatccagactaaatgactgatattaaaatgaaattattcttaggatttgcaatcttagagaaaactttttcatttttatttttttgagttacaaattatcttcatttacatttgagaacagtgagtcacagagggattaagtaacttactcaagatcatacaagtctttgatttgaacccaatcttttaactctgcagaactcagagtcactcttatttggaaaaactttttaactgatgtggatcctctaatatgggcttcctattattcattctctattagtcagaagttttgcaagcagacagaattcattttgccaattacgggattttccctcagttgcagtcaaggttcataaaactataactctttatctttaattagaaatgtttttttttttgagacaaggtcttgctctgttgcccagactggaatgcagtggcatagtggcccattgcagctttgaactcctgggctcaagggatcctctgcctcagcctcccaagtatctgagactacaagtgcgtgccatcacccatggctattttaaaaaaaaaaaaaattgtagagatagggtcttgctgtgttgcccaggctggtctcaaactcctggtctcaagcaatccttctgccttggtctcccaaagtgctgagattacaggtgtcagccgttgcacctggccaaaacgataacttaaaatacacacacacacacacacacacaaacacatatgtgtatttgtgtgtgtgtgtgtgtgtgtgtgtctcaaaaggtatcaaaagagaatagctataactttagtgttgatcttgatagtgacttgattaggctctgtttaacatcaaagatgcaaattaatactttctttgaacatattaaaaatgcagaaaatattggagtattttattttaaataaattgtattctgtatatttaaggtatacaacatgatgttatgggatacatataggtggttaaaagattactgcagtgaagcaaattaacgtatccctcaactcacatagttacccattttttttttgttttggtggcaagaggagcttaaaatctcatttagtgtgaatcccaaatacagcacaattttattacctatatacttcatgttgtacattatatttctagacttgttcatcctacatatctgctactttgtatcctctgagctacatctccccattttctcacttgccccccaagtagtttcttaaagtgtctcatgtaagagggcagtagctttcagcttaaactttttctctgtatgtagtcgatttctttgaggtatacttttctctccagaatagttagatgtaggtataccactttgatgttgacactagtttacctagaacttatcttctgtaaatctgtctctatttccatctctgtctccatctttgtctctatctctatctgtctatctctatctatctatctatctatctatctatctatctatctatctatctatctatctaaagcaaattcatgcccttctcctatttattgaatcgagaccatagacaggggtgagagaaagaatttggcaggaatggggatgtgtattatctgtggcataaggaaactttacagaactaggttcaaaagtatactttctagttctttcccatggcttttcactttgatgtagtccttatcaggtaactgaggttttatataagtcccctgattcttagaacatgaaggtgtagtagtcaaggttggtcccttgaaaccacaaattttgtgaaaaaaaattaagaaaattgaataatttcctcagcaaatacatattgatcatctgttatacagccatgagaagtggttctgttgcacacgtttattttatcagatcctaatcccaaaccaggcataaaatggaaaccatgaagataggatgaaataacttctgaatgtttgaatgtttgaaaatagtgtacttaaaaataccaggtggtttttgtttgttttttgtttttttctttttttgagacagggtctcactctgtcacccaggctggagtgtagtggtgcaatctcatctcattgcagtcttgacctcccaggctcaggttatctcccacctcagcctcccaagtagctgggactacaggcacatgccaccacgcccagctaattttttgtattttttgtagagacggggtttcaccctgttgcccaggctggtctagaactcctgggcttaagcgatcctcccacctcagcctcccaaagtgctaggattacaggcatgagccaccatgcctggcagaaaataccaggtttttaagtatcagcacttactcttcaatcttttctattactatgttgtgctaaatggtattttttatttaattagagcaatgctgttcaatagaactttctttgaggatggaaatcttttatgtttctgctatgtggtacagagccactagtgacatgtggcttttgagcgcttgacacatcttgtgcaacacaggaactgaatttttaagtaatttatattgccacatgtggctaccgtatgggacagtgtagtactagatgatctgtaagggctgtgcttcatcagtgtcgttttttaactgacaaaaacctttagttttttttttagtaatgtgtttatttaaaagaattcataaaatacaagtaaacaaattaacttgttacctgagcatatgtcctttcatacttattttttctgcatacatattttggaaaatggaatatctgccctttttttttatctgagatacagtctacctctaaaaatacatgattctaacattctcacttttgttggcatttgatcagggtatagaaaaacagttaaaaggacagagaatggttgagagattatgatatgaagagaaaatgtgattgagtgtggtagacttggggcctgcttgaatgttgagagaatgactgttttccgataaaaaaaaaaagtccattctaggatcctaaaagaagggtctgaagttcactgcagaaagcaagctacatagtactaagccactaaggggacatggagcccttagtaattcctaccttagtaatagtctcatcatgccctcttgggaacccagccttgttgattagcctctctgctttctctccttatagttcaacctccctgtttgttccaagcagttcttttcctgcccatttattatgcatttctatacagctttcctcctctttttctataccatgctgcagttcttattgctacctagaggttttcaaaattcctaggggcggataagtaggcataaacaaagttcttccctattatccttcctattttttcacctagactgaagaggtagacaaaatagaaataaagacattaagggtatgtgtttgtagtcccaaagagcttctctggcaattttatgtagttgacagtgacgctctgagttcaggacagattggactccttggctgagaggagtgaggagataggacggtagaggagagggtagagcaactctggaggaagctttcccctcacctttgccagtcctgttatcctagacttaaccataattaaagatgagggaggcactcagtaaagggatctagtgggaagcttgttccagacagccaaggagggaggttcgcgcagttcctttggccacccaggtggggtaattgatccatgtatgccattcatgtacaatgtaggcacttatacctgtattccaatgtagtgaactataccattactcttaaattaatattctttattagcttccatggtggctataggccaggcaagagagttaagaaaaaataaatagccaggtatggtgactcaagcctgtaatctcggcactttaggaggccgaggcaggaggatcgcttgagtccaggagttcaagaccagcctgagcaaaatagtgagatcctgtctctattttttaaaaaagccttggggcaaacaggagtatggaggtttggatgctaatagaacagcagtgtcttactgcttggagttctcttgtttcttgtcctatcaccgtagcctttggatcacagcaatttttccatgactccatacttttcagttcttgaatattttttcctttattcctcttgtctctgtaaagacatcaactggagttggactgtaataccaggtatctccagaagatggcactatttaacagattttataaataatttgatgtgagtcactgtcatctgaagcttgttgccttttctttctttcttctttcttttttttccccatcaattctgtatgtttgaaatgctgggttttaagttagttagaataagggatgtctgtaatttccctaaattgagaagtaatatgcaaaggttgatatcagaagtcatatgctcaccttgcaacaccaaataatactggcccatttgtgatttttgaaagtaacactccataataaatggatgtatatatagaagcataacaaaaatagaagcacataaaagtgaaaagtctcataaacgccattgtcactactcatgtaattgctgttacaaatttgtttaaatgttgaataaaaatggtgtcataggcaacacagtgttccactacttggtgtttttaatagcattattctgtctcagtgtgctttggattatcaggtgctttttaatagttgcatggtattacattgtgtagatgaacttgattaatttaaatggttccctgttaatggacatgttggtttgtttttgtgaacaactgatacagtgaacatttattttttaaataaaaaaaagagagacagggtcttgctgtgtttctcgggctggccttgaactcctggggtcaagcgatcgtcttgcctctgcctccctgggattacaggcatgaagccaccgcacccggcccagtgaacactcttgaatgtatctttgtatacttgtcagtgtttttgtagcattgattcccagaagtgggattactggattaagtgacatgcatgtttgcaattttaacaggtattgctatgtcattttcaaaagaagctatgccaattaatactctcaccaacaagagtgcttatttcccctcagcatattatcaggcttaagttttgccagtatgggtgggagaacagtagaatcacattgttttagtgtttgtttctcagatagatataattttacaccttataaccttctcttctataaattgtctatttgtgttcattctccattttcctatgggttcttattgttggagcccaatatataaaagggggtatttgttacagaacctcttcagttttggttcatgtcatgcctgggtttttaccctttctacggatgttaaaaaaaattctctattttcttccagtccacttatggctttattttttacatttagattttaatccgtctggaatttatttttgtgtatgctgtgaggtagggaccatacttttattttttcccaaatgggttactagttggccaaacatcatttattgaataattcatcttttccctactgactcgaaataccatctttattgtatactaaatcctcatatagttctgggtctgtttctgggctctactttgttcatttactgtgctggtactgcaccgttgtaattgctgtggctttgtggtatggtatggcttgctctctgctagggcaagtcgaagctcttttgttcacctgctctttcacccaaattttctgtcctgaatccagcacagccaaattatggtcattgtcaccaccaactacagtgggtgttgagcatttcccattgaatctcctgtaagggttttattggattctgtgatagcagtaaaatgggagcctaagaggtattccttaaaggactactaatcagacctggtttcccagatgatgctgaagatgacggggcctgggctagacttttgagggacatatccttggggttgggtgtgatatagaccagcccttacaatttgcttgactcatgggaatcgtacagggccagaaccagacacctgtcatgctaataacttccctcacaattcagaaatcactgtgattgaagatgggtggctgttataatactacccacttaaaaatggatgtaacccattttttaggactcttaaaaacatcaaatcagtaatggccgattaggactttttaatttttactaatctctacttgaaagttttctagtcattcatttcaggaaacctaattcttataattcatatcatttagaatatcataatgctatggatattagctagctaacttctcaaatcttctagttctcatttaatttgaagtttgtgtgtgtacataaggatatacatatacatatgtgtgtgtagatatatatatatatagttttttttttttttaactagaatgaccagtcaacaggggacataaaagtaattggtggagatgatctctcaactttaactggaaaggtatgtatcttgaaagggaagaaaaaaaagcacttcataccgagtcaattagtaacagtgtgctttcaatcaatcactaagagataatttacatagtataactaaatgggttatttaacccttggaagcagtctaggttaattatcgttccctaggtcatgtagtaaaaagacagtagaatccaacattaaccttaaatgtccatattgtcaagtactgctgtctgcctctgtgggactctaatttgggatccttcaaaaaacattgatgggggaaaagatagcctttaaaaaaaaaaaaaaaacaaacctatgtgagtctatgtgaggtagactcacatagtttcctaaaagatagcaaagcagtattatgtagtggctgaaagtgtgagttccggagcctgacaactgattcaaagcatggcttagtacttcctaactctgaccttgggcaagttacttaacctctctgtgtcccatatgtgattagggtgaggttgataatagcagccatagagttaagaggattaagtgctataatgcaagtagagctcttacaacagtttctggtaaatcactcaataaattcagacatactattattttaagaaatctcaaagagttttcttgtaccttaaaattctcctagtgtgaaccattggttttggtatattgtgcttccatgtagtttaatatcaagatgtttttagatttcccttttaatttatttgttgacccattggttgttcaggagcatgctgtttacctgaaaataatggagatattaaggtatttgaatatttatcttctagtacattgaaaaactttttgagagtaaccaataataaatgatggaatgctactgctttttttttttgaagctgccagttattgtttacttacactatgccaaatataaaggcattaatctcataaaagtttcacaacaatcctgtgagggagacgatatccccattttacaaatcaggaaattaagacttaataaggttaaaagacttgcccaaagtcacagaaccagtaagtggtagagcttgaatttgaatacagacctgactctaaagctcttttctttctttagattttagtgttcattgcttacttgaatgagtatctataagaaaactttaacatgtaaaacttctgtgaaattatcttgtcccatatcagggtcatgtcaaactaatgtcctcctcagcatctttggaaaacttcagaggagaaatgagctttgcccctcctgttcatttcatataccactgttagacctgtccttccctttcagcatgctttgtccatatttagaagctgttgaagccattacttgtctggtcagtttttagtgctggaatggacctagccttttaggccttctgagatttagtttgatctcgtctttcccacctaatggctctgttctactacatagatttgatctgaaacagttctctgtttctaaaataactttcttttcatgatagtcacagtaaagtacatttattatggaaaaatcaataagtataacgagtgaaagttatttcttggtggtaagattatgggattatttgaactttctgtttcattgtattttatttatttatttatttttgtgatggagtctcactctgctgcccaggctggagtgcagtagtacgatcttggctcactgcaacctccccttcccagttcaagtgattctcctgcctcagactcccaagtagctgggattacaggcgcacgccaccatgcctggctaatttttttatctttagtagagacagggtttcaccatgttgaccaggctgatctccaactcctgatctcaggtatccacctgcctcagcctcccaaagtaccgggattacgggtgtgagccaccctgcctggcctcattttgtcttttgggggtatttttgtgtgcagatatatatgtatataaatatttttccctcttttccccagttagtatttgagcagatgaactttggacccgaatacctgtattcaagtctctaataccacttcttggctattttcattttatcaaatggcctcttatcctcgtttttctcatttattaagtagagatgtaactacttgatataattcaaaaactcaataatggcattcttttgttttttagactctagtgtctgtactcgttgtaccatgctgggattcatttgaacaattgcatggcttttttagtgtattattaaatttgcagtttacttagaatttactgggacctcatacaaatgggaaaaaaacataactgtgttactcatttgctgtgtgcctttggattgaccctattttttgtattcattttctccccatgtcctgagttccactttgaataaaaagtaatttttttcctgcctgtaaaataggctaccaataggctgcagttgtctatagtagctgcttcactgaggagagctcagcatgagagaaatagtatgaattgcttgccacaagttatgggctagccttacttcattctgtacttggacctgtttaggcttctaagagatcttacctccaacaataaactgctttgagacatgaaaaggtggaagctttacttggttataactttacttttaatacctagaacagtgagtcttcaaacttgtatttgcatgcccaatttataaaaagtttcctgagcatttacccctaatatatgcattttaaattatatatgatttatggtaataataatatatatgttacaaaatacatacaaaaatatagattaaacaaggtgaggtaaaaaatttaaaagttctaatctttcttgcaaaccagtggatcttttgtgccttactctggtaaacactgtcttagaagaatatatagaacattaaaatcttaatgctatagttatatgacagagtatgatgagagctacagataaacaacacatcatgaatcttcttgtggcagtgtttataaccattatgtgaaatgctgcctcattcttataactagcataagaacagataggactttctcgattttgaggggtaattattagatggtattttctgttaaggactcttccagctataaaattcttaaatgtagaaagcgaagtgagggtttatggtgagaggaagcattggtatcatgttttagtgtagtccaagaatatggacacatccagaaaatgcagatcaagtttagcctaatgagaaaatatattttggagtccatatggtaaattaaattatgtgatttttgagttattgtacaaatataattcttagaatgttagagtcaggagactataagagaccaactgcttcaagtttcatttaacacatgggaaactaaggccagagaaatttcaagacttgcccaagattagacctcttgttaagtaatgaaagtgttttaaaaacaggtgggtcaaattctgtttttaaaatttccattatgatgaaaatttcagtattacaggcttccaaatcccagcagatgggccacttgtttaaaggagagtttgatataataaagcatctaaaaacaagagtttggataattccttagggttgttatgatgtgatttgacttataattggaaataccgttttattcattgtactgattttcatttctctttttcttctagaatgtcttgattgtggaagtaagttcacatttacttttaatataacatttatgacttttctaacttagtatgcaccatcctaaaggtaagccagggagagaaattcctctgcatcagttttaatggtgggcttgtgttctaaaggagtgagattggttttttgtaaagactacttagtaatttgtttttaccaataatggaatggtatacttcctacctctctttttttagtttgaagtattttctttctaaacataactctctctctctatttatctatatataatatatacatatatatcttatattttatgtatatatatatatatcttgcttagattttgtcttatgtaatatttggtacataaaaaataatatttataatttatagactattttccatgtgttattatgtgctaaagtattttgtatcttagcaccgagaggctaagcagtttcctagggttaccagctagtaaactaagggaaacctttacttcctttagctcagtggttctcaaaatgtggttccctagaccaaaagtattaatatcagacaagaacctaccgaatcaaaatatctgtgatgaggcccagcaagctatgctttaacaagtttccgagtgattctgatgcatgctaaggtttaggatcccttgtttttactcataagtcactttctcattaaggccttccctggccatcctatataaaatctcatgttttcacaccgtcaacttcgtattcctcctcaatacttttattttcctgatcacttatcactaacagcctctctctctctctctctctctctctatgtatatatatatatatatcacttatcactgtctaacagcctctctttatatatatataatctatagattatatatatatgcagcattgtgcaatcattatcacgctcaattttaaaacattttcattgccccacaaagaaacccaatccccttagccatcactccccatttccccttcccccagcacctagcaaactgatcatctacctacttgctgtctataagatttgcctattctggacattttgtataaatagaatcatacaatatgtggccttttgtatctggcttctctcacttaatgttttcaaggttcattcatgttgtggagtatatctgcactcatttcctttttattgccaaattgtatggatagacaggtgttcctcaactgtgtcctgataaacccatctgaagttgaaaatatcataagttgaaaatggatttactactttgataaatctatcctaaagtcagaaaaatctcatgttgaaccatcgtaagttggataccatctgaattacatttttgttatccattcactggttgacagacgttaggttgtttccactgtttgctccttatttctcgtacctgaaatgtccttattccctcccttcttatcccatgtttaagtcatttaagacccagctcaaacgtcacctccacaaaaccttccttgatacccctttcctcttcaattcacttggaccttttgcatttaattttaatttttattttttttaagacagagtctcactctgtcaccaggctggagtgcagtggtatgatctcagctcactaactactctgcctcccaggttcaagcaattctcatgtctcagcctcccaagtagctgggactacaggtgtgcgccaccatgcctggctaattgtgtgtgtgtgtgtgtgtatgtatgtatgtatatatgtgtgtgtgtgtatatatatatatacacacacatatataaatatatatacatatatatatatacacacatatataaatatatatacatatatatatatacacacacacacacatatatatatatatagttttttttttttttaagtagagatggggttttgccatgttggccaggctggtctggcctcaagccatcctcccacctcggcctcgcaaagtgctggtattataggcatgagccactgtgcctggcctgcatttcattttaattataaaatattttgaactcagaaaaaagggtatgctgaatacctacgtacccacaaaagtattaacattttgccatatttgcttctgatcttattttttttgagaaattaaagatcataatacaactaaagccccatttctttcccttcattcccagaagtatgacaattatccttaaagttgatatatatcattcccatgcatgttttttatacttccctagtacaagttagctgtatcctctgctcaggggctcatcaagctgaatcaagggactcatgatcctcttcaaagttccttcaggttgttggcagaatttagttccttgtgattgtaggactgagggcccgttttctcactggctgctggccaggggttgctcccagatatttaaaggctcatgccctagcccatgacagtctcacaacatggcagctgacttcttcaaaaccagcaggagaatcttgctctagtctaccacataacctaatcacaggagcggctatcccgttattttcacagatcctggtcacattcaaggggagggaacccttctgtgtgtgtacaccaggaggcaggaattttttttttctttttcttttttgttaaaaagtcttaaagtcttttatccctaaaggaggcaggaattttgagagccatcagaattctgcctaccacagcccagaaatctgcatttttcacaagtctccagccatgatgtttctgatggctcacactgctttattccatttttaaagagtatttttattgaaaagcattagggttatggtttaaaaaatattttccctaacaaagatgggtttgtttagagtcctacttttgactaaatagctgagattcacttttatgtaaagtcattttatagcgttattaatttgggtgcctttaaaaatagtataaagcatgtttctcgagtgtagtctgttagccacctatattggagagttgggaggagagagtctctatcttgaatttatgggaaaaattctaaaatactttttataatgaaggacaacatcataactccctaataaaatgtgcatgtatatattcaaatttgctgtcattgatcctgcacctacaaaatccagtcctgggggctggcattcttactgcttgctgagggccagatgatatagattccagaatatctccatgtagattttggtgagaattactgtgctgaaaagaatgacagtattgcagttatacatgggggttttggtactttatattgtgactctgaatttaaagctatgcaatgtcttcttttttgaaaggatataattgacactggcaaaacaatgcagactttgctttccttggtcaggcagtataatccaaagatggtcaaggtcgcaaggtatgtatgacattttgacacagaatattttcctcatttgaagggggattaagtgattgcttctttttaaggataaatgttttcaactgtcattttatcttcgaaaagtaatgtaatctcatataagacttaagatataatccttttaaataattttgtcatgtgttaataaagctcataattacagtcacttccttgcctaatattaacatttggtttttcagcatgctaattatatcagtttgtcctgaatagcatggcagaggattttgggcccccttgcaaaattaagaataaggattccaaagcgggtgaggaagtgataggaaggggtgggccctgaagatctggacctcctggaattgagtgatgaatgctgcatcttctttgtgtctgtagtgaaattttataatgcctgcttccttttttattaagtcggcctcacctcctcaccttacctatgctgttttacttttgcttttatagttctacctgtgtttatttctcattttcgtttcatctctcaacaactctggggtggcattattattcccacttttcagataaggttactgaggcatagggaattgtccaaaggtacagagctagtccgctatagagatgagatttgaacccagggaacctggctcacagtttatgcttttgctaccttaagtttttaatagagtgacatcaaacaaacatttaagaatatgtttttcttttccttttataatttcattaaaaacattaagtctctgatcagtctgcagtttttatgtaggggtcaggtaatgttctaacttctgctttttcctaagtgattaacaggtttttataagcccttttgaaaaaatcacggtatctgtcgagcatctttgaatcagagtaagccttctagtgagtcatatgtcagcagtttgactgtatgggcttttctaatatccagttcaagtgtttatcagtgagtttttcttttaaatagatttgggacaggtactatgagagtatataagtgatacgttataggacactaactagtatcctatgaaatggcaaaaactgcaatcacttttgcaccaaccaaatagaaactaatcagtgcacttgcttatttttctacatgctctttagggttttaaatgtcaacctactgtggcatagactttaatcctctgggtattcttttgttgttctttcctggtatatgctgtggaattgagatagactggttcgtgagcgagagattttgtgttgccacaggtaggacatgctcaaacaatacttgggtcatttcttgacccaagtcatctattcaccatagttttgtagcaccgatcttgcatacatttcatgtatcttctttgaaccccacgtcagtgctgcttatatgatactcagaaattaaacactaaggaataagattttcaggtaggattgagttttggagggtcacaaatcttgtaatgtctaatatttccactctccctgctgagaattagttttggcttccttggaggtgatatcgcctctgttgagtataagtggcctactgtgatcacaccactgcactccagcctgggtgacagagtgagaccctgtctcagaaaaaaaaaaaaaaaaaaagaatgcatggcctagatgacttctaaggtttttcccacccagttccagttttcatgttctaggcagagcagtaaagtgagaaacacatggacttgggagtttagtctcgcatttcactgccacttaatctgagcgactattccatatttaatctctctgaatgtatttactcatctttaaaggggaatgattattaacatctttttctcagggaaactatatgagtcaaggagataatatatttgaaaatctttttaactgcaaagcgctgtttcactgttggttataatgtgattgatctcattgtagtgagcagctgcttaattgcgttttagaatgtagggaagatagtaatatttttcacattatatatgtagctggttctggaactgtaaacatactccttttttatggagatctgagtcacgtaccataaaattcactcttttaaagttgtacaatccagtggtttttgatatattcagagttgtgcatctgctaccactatttcattttggaacccaaagaaaccttgtacccattagcagtcattctcccttctcccagcccctggcaactactaatctactttctacagaaagtccgtacagatttgtgtattatggacattccatataaatggactcatgcaatatcctgtcttctttcacttagcatagtgttttcaaggttcatctaggttggggcatgtatcagtacttcatcccttgttttggctgaataatatttcattgtacaaatatatcacattttgcttatccatctgttggtgaacatttgagtttctacctgttggcttttatgaataatgttgatttgaatgtttgtgtacaagtatgaatacctgttttcaggtctcttgagtatatagttgctaggtcatatagtaactctgtgtttaacattttgaggaattgcccgactatttaacaaggtatatgtactgttttacaccagtaacatatgagggttccaatatctccacatccttgacaacacttgttactgtcctttttattgtagccatcctagtggctatgatgtggtatctcattgtggttttgatttgtgtttctctgatgctgatgatgttgaacatgttttcatctgcttattggccatttacatatatcttcttaagaacggttacccatttacagtatggaaaatgcttcagatgcaactctagtcatgccttagagatggagctttattaaacattcagatctctaggcatatgaagtgctgagttctcttgaactcctaatacagattgcactgagtttagtgataccttttctggagcattcctgagttcaggtagggagaagggtttttgctgtgattggcttgttatgttctttctaaatggaaatagaattgaagtgtctcctctctccatttattggaagagtcatgagggacataattagatgatcccttggagtctccggcttaggtcagtggttatctacttaggctgcacattggaatcacctgagagttaaaaaaccaggataacctctgcctgtgtctcatctccagcaattctgatgtaattggtcagggctgtggcccgagtaggtgagttctggttttttaaagctcccaggtgattctgatgtgcaatccaggttgagatcactttgggccctttccagctctttaaacatatatatttatctaggaaggtatgaaagcataagttttcttgagactgcctttaacatctgtaaaggctttcaaagcagcttctgtagttttttttaaatggctgaatatttttcaacaggcagcatttgggttataaaattagcttttggtagagttgacttataccacctccagcttttgttccaaaaataaatactggttcttttggcacactagttgttttaccctaaagttcctctttgtaagccagttattaaaagttgtgatgcagccagggcgaagtggtacacatctgtagtcccagctactcggaaggctgaggggggaggatcgctagagcccaagaagtcaaggctgcagtgaactgtgattacaccactgcactgcagcctgggccacagagcgagactcatctctttaaaaaaaagaatgttgtgaggccgggcgcagtggctcacgcctgtgatcccagcactttgggaggccgaggtggacggatcacctgaggttgggagttcgagaccagcctgaccaacatggagaaaccctgtctctactaaaaaaaatacaaaattagccgggcgtggtggcacatgcctgtagtcccagctactcggcaggctgaggcaggagaatcgcttgaacctgggaggcagaggttgtggtgagttgggcgagccattgcactccagcctgggcaacaagagcaaaactccatctcaaaaaaaagaaaagaaaagaaaagaatgttgtggccaggcgcggtggcttacgcctgtaatttcagcactttgggagaccgaggtgggcggatcacgaggtcaggagatcaagaccatcctggctaacacagtaaaaccccatctctactaaatacaaaaaaaaattagccgggagtgctggcgggtgcctgtagtcccagctactcaggaggctgaggcgggagaatggcgtgaacccaggaggcagagcttgcagtgagcggagatcgcgccactgcactccagcctgggcaacagagcgagattccgtctaaaaaaaaaaaaaaagaatgttgtgataaaaggtgatgctcacctctcccacacccttttatagtttagggattgtatttccaaggtttctagactgagagcccttttcatctttgctcattgacactctgtacccattaatcctccttattagctccccttcaatggacacatgggtagtcagggtgcaggtctcagaactgtccttcaggttccaggtgatcaaccaagtgccttgtctgtagtgtcaactcattgctgccccttcctagtaatccccataatttagctctccatttcatagtctttccttgggtgtgttaaaagtgaccatggtacactcagcacggatgaaatgaaacagtgtttagaaacgtcagtcttctcttttgtaatgccctgtagtctctctgtatgttatatgtcacattttgtaattaacagcttgctggtgaaaaggaccccacgaagtgttggatataagccagactgtaagtgaattactttttttgtcaatcatttaaccatctttaacctaaaagagttttatgtgaaatggcttataattgcttagagaatatttgtagagaggcacatttgccagtattagatttaaaagtgatgttttctttatctaaatgatgaattatgattctttttagttgttggatttgaaattccagacaagtttgttgtaggatatgcccttgactataatgaatacttcagggatttgaatgtaagtaattgcttctttttctcactcatttttcaaaacacgcataaaaatttaggaaagagaattgttttctccttccagcacctcataatttgaacagactgatggttcccattagtcacataaagctgtagtctagtacagacgtccttagaactggaacctggccaggctagggtgacacttcttgttggctgaaatagttgaacagctttaatatacaataattgttgcattattatttcagatgataaatgtggtcataagtaagaaataaatgatcgagtttagtcttttaattcactgtcctttgaatacctgcctcttactctggaggcagaagtcccatggatgtgtttatgaacatggttgaggaagatttaggaagactgcaacagtacactacctaaagcaggttttttactccatctttttttgccacgtacactggcctcccactttgatatgcttgaaattatctccttgatttgtctttcaaaactacatattgaggctggttgcggtggctcacacctgtaatcctagcactttgggaggccaagccggacagatcacttgaggtcaggagttcgagaccagcctggcaaacatgatgaaaccccacctttactaaaaatacaaaaattagccaggcgtagtggtgtgtgcctgtaacccagctacctgggaggctgaggcaggagaatcactggaacccgggaggcagaggctacagtgagccaacatcacgccactgcactccagcctgggtgacagagcaagactctgtctcaaaacaaaacaaaaaacaaaaaactacgtattaagacaagaaacagactgggcgcggtggctcacgcctgtaatcccagcactttgggaggctgaggcgggcggatcacaaggtcaggagatcgagaccatcctggctaacacggtgaaaccccgtctctactaaaaaatagaaaaaattagctggggtggtggcgggcgcctatagtctcagctactcgggaggctgaggcaggagaatggcgtgaacccgggaggcagagcttgcagtgagcagagatcgtgccactgcactccagtctgggtgacagagcaagactccgtctcaaaaaaaaaaacaaaaacaagaaacaaattaaactaatgtgatagactactgctttgttttcaaaagatacactccccaaaagttactgatctaaaatacagtagtactatctctgtttagtaagaaccctgacaactaatagtgttcttatatgtaaaatgctattcttgcctttcatttcagaatatactttttaaatgtgaatttctggatttttttttatagcatgtttgtgtcattagtgaaactggaaaagcaaaatacaaagcctaagatgagagttcaagttgagtttggaaacatctggagtcctattgacatcgccagtaaaattatcaatgttctagttctgtggccatctgcttagtagagctttttgcatgtatcttctaagaattttatctgttttgtactttagaaatgtcagttgctgcattcctaaactgtttatttgcactatgagcctatagactatcagttccctttgggcggattgttgtttaacttgtaaatgaaaaaattctcttaaaccacagcactattgagtgaaacattgaactcatatctgtaagaaataaagagaagatatattagttttttaattggtattttaatttttatatatgcaggaaagaatagaagtgattgaatattgttaattataccaccgtgtgttagaaaagtaagaagcagtcaattttcacatcaaagacagcatctaagaagttttgttctgtcctggaattattttagtagtgtttcagtaatgttgactgtattttccaacttgttcaaattattaccagtgaatctttgtcagcagttcccttttaaatgcaaatcaataaattcccaaaaatttaactgctttatgaattcaatttaaaaatccttaaaataagtcctgtctctttaaaaaaacctatgcatagttatcatttctctacaaattaacctagtttagttttctgttggttccattttccttgtttgttaagttttagtagctagtttaattgtaatctcaatgattatgtggtagaatgggttggcggagctacaaaaattcctagctacttcagagacattaaatttcagacacatggtacactttatattacattttactatgctaaaataacacggctttcttttggaattctgttcagtttttcagattgtaatctcagctacatctcaacagattgttctcagatatgtcctattaccttctttgtgtagatagtgctttattgactaagaacaatgacaacaacaccttttgttttctgggaataggagaaaagttttaagccaaaactcttaattgcttatctgctccacgtgaggtatgaactatcaaacttaggagccatctagcttacacgtgttccttaaaaagtttgctgtaggccgggcacagtggctcgtacctgtagtcccagcacttttgggagcccagggtgggggatcacttgagctcaggagttcaagaccagcctgggcaacatggcaaaacgccatctctacaaaaatacaaaaaaaaaaaaaaacgctgggtgtggtggcgcacaactgtagtcccagctacttgggaggctgaggtgggaggattgcttgagcttgggaggtgaaggctgcagtgagccttgacagtgccactacactccagcctggatgacagagtgagaccctgtctcaaaaaaaagagtttgctgtaattcccagcaacaaagtaggagactcaaactaaataattttctatagtcctagaacttcttagtttacaaaacatttttacttctgttatctcatttgatcttcatacccatgtaaggttgaggtagatgttaccacatgtgagtgcaatatccagaactcctgaatccccttcttcccctaaaatgtcagcccgctgaggtccacttggctaccctcttgaatactgcatccagcttcccactgctgaacctctttactctttttttttcagttgcacttaccaccttctagtaagttgaaccatatgaaattaccatttttgcaggtaaaaaatggccggtgataggcagtttggcgtcgtataacccaataacatgttatataatttacccacaagtggtgggttgctatgtcctggaggagtcagcttcagactctagctaaatgattgtataaccttgcagctctcccctaagtgaggaggcaatgttgaaagtcccatgtcttatcagaaccagggaggcagatgagaaactgccttatggcagctcccacaacatagggaggtgggtgacaaatggccttgggacagcttcttcccaagactggttatgttacagtgttcctgggaggatcacatggcattcctccaagatgggtcagactgctgttggccttgtctgtgtggcgtatgtgaagacattcatggcagagctgttcccttagaagcatctactaaattgatcttttcctttcttacttactgtctgtctcccttagtaggctgtcagctccgtgagtgcaggaccttgccagtcctggtcactgctatatccccagcacctacaagagtgcctggaaaattgtagtgctcaataaatatttgttggataaatgatagaatgataggaagttaaaaagcaattaaaatacttgaaaagaagcaaaacatttttcatgttaagcaaaaaaaaaaaaaaaacttattaaggatagctaacatgtattgaattctatatgcaatggaatgatacttagcgcctttgaatccttatgataaccctataaggtaggttgtttgggtttttttaattgtcccaactttacagatgaagaagtgcaggtccagagaggtcacataatttgcccaggatcacacagctagtaagtagcagatgaggaatttgaacccaggcagttgtattccaccatctgccctcttagttcattgccacttaacctataatgcccagctcttgtgtagaaattaatacactgataacatagaggaaaacattaagctcattgaatgtaataagtccagatgacttgtacattaaacacagctttttgaggtcacagctgatctctaagaatgtaaactgatttcctctggcactaaaaagcattttcaaagactgttaagagagtttctccaacattctcttcagatttttctgctggcttattttatgattctgtggacagcttcagacaaaataactttctggtatgaaggattgtgtttactctgcttttttttttgttgttttttgggttttttgttttgttttgttttgtttttgagacagtgccttgctctgctgctgcccaggctgagtgcaatggcatgatctcggctcactgcaacctctgcctccctgggctcaggccaggtgtatgctaccactctcagctaatttttaatttatttttttagagatacggtcccactctgtttcccaggctggtctcagaactcctgggctcagacagtcccccgccatggcctcccacagtgctgggattacaggcatcagccaccatgctcagcttgttctgccattttcaaatgtgaattttatagacactttaaaccacttgaaagagtgatgatgttttaatgattttcattattatttgcaacttcaagcattaaacactgccaaattaagtttcaagttttctctttacacaatatggatgtacttcataatggacttcctcatcatgattaatgagtgaagtgacattcaaacttggtagcttttcagtagaacttcctttcccaacattttttctgttcctttaattatggcaatatctgagagctctgaacataagtcaaaggtttgattatttttcatgtggcttcctctgcttggaactttctgccccgcatcttcccgttgccccctgtgtcctcttgtcatgcccctacccttttttgagtgtgtctattttctggcactacaagacataacaggctcatcttgtgttttccctaccctgacccagaatcagccattacttcaaggagccctggttccattattggagaatactattagaaaccaggatctggtgctaggcatgctcatttctattggagtgtcatacaaacaatttgtaaattgtttgtaggtcctcccagtggataggattaggaaataaaacatgcatactaaccatgcatacacacacatctacgtctatttctgtatctgtctgtatacatattaaaataaacatgggttgataactaatgtttctgctgtaatccacagccttcatcctagcctgccactcttcttctttttagctttttcaacagtgggaaatgtggctcttgttatgtacactttattcacttatttgtttgaccctagtatcataaagtagttccgtatgcctgtaacagatcgactaactagagtccattatttgcggaaagatctttttgtccgaagcgttaccgcaggggtgtccaatcttttggcttccctgggccacactagaaaaagaagaattgtcttgggccacacgtaaaatacactaacactaacgatagctgataagctaaaaaaaaaaaatcaaaaaaatttcatgatgttttaagaaagtttactaatttgtgttgggccacgtttaaagccatcccgggtcgcaggttggacaagcttgccttacagtatccagtcaaaataatgttttccaaaattacttcttttctttttcatccctttcagtgtggccgttatttataatgcagtttggttcattagtgtttttattacaaatacaccctcagccttcatatcctagttttaatgaattattacggtgaaacataataagagtcagagctatacagaaaggtctactcagaggtgctttgttccctcctattctgttcccactactcctactttccactgaccctgtaagcatcatatttatttttaatggcagttacatttttaccaagtgcttactatctgtaggcacttggtgtgtattgcttcttttggtgttcacagcaacctcttgaggtaagcactattattatcccccctttttcttttttctttctttctttcttttttttttttttttttttgacagtcttactctgttgcccaggcaggagtgcagtggcgcaatctcggctcactgcaacctctgcctcccaggttcaagtgattctcctgcctcagcctcctgagtagctgcgagtacaggcacaagccaccacgcccggctaatttttgtatttttagtagggatgaggttttgccatgttggccagggtggtctcgaactcctgacctcaggtgatctgcccgcctcgacctcccaaagtgctgggattacaggcacgaaccactgcacccggctattatccccattttttagatgagaaagctgaatcccagagagcataagaagcttgtccagagtgacatctctgatgcataaccagtactcaaacctatttttctgacaccaaggcctgtgtgtaaactgtaaaggggctgcttggcacctactttcctaaagttgtcctatcccttctctgtctgggtcttcctgaagcttggcacttctgaagtcacctctctgaaaacattctggtaactgttaaatcccttgttctagctattcatgtgttctgtgtggttaaacaaggttcacaatgggccacctggcctttggaacttgggtgaagaggctgccttcagttgatcctccccactcccattttcaaaacatgggtttacatgagttatttgtgaattaggaaacataaccatgttttgagccttcatagaaaacaaacgtctggggtcatacaggttaaaaggagtaaccaaattcggcactatcattgttctattcagtagacaattctggggcctttctgtgtctcaggttctgtactagttgtttcaggactttgggataaatacaaactatccctgccctcagggggcttaaggtcaggtgtacaagtgactctaatgtgaggcaaggctggattcagtgctgcatatctaatgctatgggaattcaaagaggaagtgatcagaatgagaagggagggatggatcattccaggagaagcttcagggaaaagcaacatttaaaatgagacttttgagagtgagggaaatttggacaggtggatatagaggatgcaaggctagaggaaaggttttagccagaaagtctgcttgggcaaatgcctgggtaaaaaaagaaaatccactttgggaggacaaggcgggcaatcgcctgaggtcaggagttcgagaccagcctggccaacatggtgaaaccccgtctctactaaaaatacaaaaattagctgggcgtggtggtgggtgcctgtaatcccagctacttggaaggctgaggcaggagaatcacttgaacccaggaggcagaggtttcagtgagccgagattgcgccactgcactccagcctgggcaacaagagtgaaacatctaaaaaaaaaaaaaagaaaatcacagggcagtgtggggaatggtgagtattctaatttggttgtggcagagaggatgtagaaggaagtgataagagagaaagccggataggagggcctttgtgccagttaggatgttctagacttccagccaggttgcccagctcaaactggcttaaacaatgagggggtttattggctatgtaattgggaagtgcagaggtagctcaggccagatcagtttgatccactgctccattatgatgtcaaagacccatgcgatttccacctcattattctgctgtccatagagccaacttcatcctaaggccagtccttgtggtcagacaagggctgccaatagtaatctgggtgcaagtttctttgagaaaatctttctgtgtcaactctcttaaaaggggtgaaaaatctctccttaagtcccactggccagaatgggcccatgcacccatttcttaaccagtcactggcaactgggggtgggattgccgtttgcccaatcaggtccatttctggagctaagattaaactccatttcccttgggacacattgaacagaatcagaattcgatgaagaaggaagaagcggagaattggtttggtgttgggtaggcaaccaaaaataacctctgttgcctcaagtgccaagaaagtggtgttttgtgcttgttagggtaaaaatggggatcatggaaaatattttaagtttcatagaccaaaaaatattccagtgtttcatcaaatctaagaggctatcaattataagatataccattattttatgtaccaccaaggaagaaaaaatgctgccagtgaagttaggatgtattgcaggttgggttctctgggaagcaggctgaaaaggaggtgagaatgcaggacatttatgggagaacacccttgggattaatactggaggaggagaaccaagcagggttggtggggcacagggagaagttgggatgccatgcagtcacaacaaaggcctcagccaaccccacggggagctcgagaagctgagatggcccttcagtgttgccctgccttgtggtgagtgaattgggtcttcatatccccatgttgactggtcattggatgtgggctcccttaggaatgggcatctcttcagcagaggtagctttcttcaaaagaggtgattccaaagagtcacccactcactgagggctgtctgctggcagcattctcagccactactcaaagatgacctgtccaggaaggggaacctaggtggcatgacacattgtctattacaacatgctactgattataagagccgggaggtggggggcaacacaatgtctgagatattaaaatggaagtctcttagaagaaatggataattctataattatagttaatcagaaaggggaagaagtggggaaatggaccaagggcctgagagagaaaacagacgcaacaggccactagaaagataggacactggagggtgggaagccctagcagtttcttccagggtgggctgggcacggtggctcattcctgtaatcccagaactttgggaggccgaggcgggcagatcatttgaagtcaggagttggagaccagcctggccaactcctgtttcaccctgtctctgccaaaaatataaaaaattagccgggtgtggttgcatgcgcctgtaatcccagctacttgggaagctgaggcaggagaatcgcttgaacccaggaggcagaggttgcagcgaggaaaaatcgtgccactgcacttgagcctgggtgacagagtgagactgtctcaaaaaaaaaaaaagtttcttccagggtggcttctgtgccagagtcaggtgccccagctacctctaatttatggtcctcctgcactgggaaacagattttctacttttggtttcatgataaataacatttccccctgattttaaaagttatggatttggctgggcatggtggctcatgcctgtaatcctagcactttgggaggtcaaggcaggcagatcacttaaggtcaggagttccagaccagactgggcaacatggtgaaaacccgtgtctaccaaaaaaaaaaaaaaaaaaaaaattagccaagtgtggtggtacatgccagtagccctagctactcaggagactgaggtgggaggattacctgagcccaggagatcaggcctgcagtgagctgtgattgtgccattttactccagcctgggtgacagagtaagaccctgtctcaaaaataatagtaataggctgggcgcggtggctcaagcctgtaatcccaacactttgggaggccaaggcgggcgatcaattgaggtcaggaactcaagaacagccttgccaaaatggtgaaactccgtctctactaaaaatacaaaaatgagccgggtgtggtggcgcatgcctgcattcccagctactcaggaggctgaggcaggagaatcgcttgaactcgggaggcagaggttgcagtgagccgagattgcaccactgcactccagcctgggtgacagagtgagactccatcttaataataataaaataataaaaattttaaaaagttatggatctggatggagggaaatggaatgtataaaagaagtaaacatacacaagaagatacaaatacagaataaaagtaaaatgcaaccatcatcccactaccccgataccagggtatccgtttttacatcttttctttcattctttctgtctttatataattgtataaatgctgcataaacctcctcttgcctgctgcctcctcaaagacctccctccctccttcactgcccttctgctcctggagagccaccctctctccatttatccttcctatcagcttcaggttcttaccatgttaacaaaaagaaaatcttataagcctgtcactctctacatacgccgcacctcctttcattcatagcctttaaaacatatatatagcagttattgtggttatttttctgttcacaaaataaaaaaacactctttctagaaaactggaatatagaggcaagctttttttttttttcagacggagtttcgttctgtcgcccaggctggagtgcagtaacgaaattacagcttactgtaacctctgcctcctgggttcaagatattctcttgcctcagcctcctgagtagctgggattataggtgcctgccaccacacccggctaatttttgtatttttagtggaaatggggtttcgccatgttggtcaggctggtctcgaactcctgaccttgtgatctgcccatctcggccttccaaagtgctgggattacaggtgtgagccactgcaccctgccgaggcaagatttttttttttttttttaagaaaacccagttattccattacccaatgaaactctaaacatgttgatgtacatccttccaaaatttctttttatgacaacatgctttttatttttaattatttttattttattttaaggtccggggtacatgtgaaggatgtgcaggtttgttacataggtaaacgtgtgccttggtggtttgctgcacctgtcaacccatcacctacgtattaagccccacatgcattagctattgatcctgatgctctctctccctgctggctccccagcaggccccggtgtgtgttgttcccctccctgtttatgagaacactttcttgacataaagatttcatttattcccatggaattctaaaggcttttcatacttgtgaaggaataatagtttagaaataaactgaactttaaaagataccattttgaaaaataatatacagccatcaaaaattatatttatgggaactatgcaataatattaaactctatcatctgttgactgcctcctatattccagaaactttacatacaccaattctaatccttacaagaacgctgtgtaggctttagcattagatggaccaggtttcaccaactgtatggtcttggataagtacccaacctcctgtccctaagtttcctcacctgtgaaaacacggtttctaccagctttcaaataagatgatcaatataaggcacttggaacagaacctgacacatcataagcactctataaatgtctattatcaccaaataattccaggtgccttgaaaatttaaatgaaaaacaaaatcaaaccatgacaatactagaagcaaatttaggtgaacacttttctaatccgggggtgggcgggggctggggggaggcagggagaagaccttttttttttctttttgagatggagtcttgctctgtccccaagctggagtgcagaggcgtgatctcagctcactgcaacctctgcctcctggattcaagtgattctcctgcctcagcctcccgagtagctgggactatacaggtgcacaccaccacggccagctaatttttgtatttttagtagagatggggtttacaccctgttagccaggatggtctcaatttcttgacctcgtgatcccatccgcgttggccttccaaagtgctgggattaccagcatgagccaccgtgcccggctgggagaagacctttctaagcatgataccaaaggcagagacaataaaggcaaagaattgacagaattcactatccgataaaaatcacttctgtggccgggcgcggtggctcacacctgtaatcccagcactgggaagccgaggtgggcggattgcttgaggccaggagttcaagaccagcctggccaacatggcaaacctcctgtctctactaaaaatacaaaaaattagctaggcatggtggcatgcctgtagtcccagctactcaggaagctgaggcatgagaatcacttgaacctgggaggtagaggttgcagtgagccaagatcatgccactgcactccaacctgggtgacaaagtgagactctgtctcaaaaaaaataacaattaaaataaaatcacttctgaatggtggaaagcaccacaaagttagaggtcaagcaataatttggagaaaagaattagtaatttgttggacagacaaaagacttttttaatataacaaaaactttaaaaattaaaaaaatacacattcgaggacattttcctaaaaacacaggcaaaggacataaacagcaaagcaagaagacagcttgatgtggccattttatccagggggacattttggtgagccctatggacacagctgccatgatgccaacaatgtgacagctgtccccttcaaaatgcgttagccccagctcttcctctcccccaacctccagtccaaaggacttgcactttctactttactcctttctgcattgtttaattttcttttacaaatatgttacttgtcatcagaaaaaataaagaaataaataaactgttagagtgttagccccttaaaggggagcaagaatcacctttctaaaagaaagtttatgttaaatataatattagcatatgtgaatcctgagagaaaagttaacagtttagttgagttatttcctctgtagtctggagctaaaaatagggaatcttattctgtcctaaatcttttccttcctccacccagtgtctgtctggatcgaattcattcattcactcagtaggcactcactcagccaggcatggtgctaggcctcaggacctcgctgtgaaccagaaactgtccctacccccatggtgcaggcattctgcttgggagttggaggaggaacaggtaaaaaataattaaatattcaggttaacgatatattgtcaggtttgaggattgaggaaagggcgcagagagtggcaagggctgctgttttagatacagtggccaggaggcctccgatgaggtgacctttgaggagagacatgcaggagatgaggggacagtgaagaggatttctaagaacactccaggcagacagaacagcgacagccaaggccctgaagtgggtaggggcctggtgtgtgtgaggaacctcaggattgccatcatggctggagcagagacatgaagcaagaaggccatggagatgagggcagggagatcccggagtggggagatcagatggggctctgtgtatcatgcaaaggactttgcattctgttccaagagctgggaaggttgacataattaggaaaaaagcccagaaaagcagaggtatccatttttcatggtaaagatgataatttcaattaaaacacgattcctggatatatgtaatttgtaggccaaatggtgcccaatccctacctccctcaccccctcacttccctatccctaaaacctgtacctcaactcccgttcgtaagtgatgggagttaggaatagagaaatctcccggttgggttttctgagcaaagaggtaacatagcagctctgttatttctttcacgtctccaagggaaccatgactcacccttagctatcccccgggaatgtggccctcagagtgttcttttactgattcgtgattttgttatgtacacctggagtgatggaacataccataccagcttgtcagggttgctttgtgcaaagatcgatgacgtgtgtgaacccggatccatgcttggggtcctgagtttcaggtgccatggccagttgctagcaggttgtatgtgtgtgaccagcccctatgtgagtctctcagaccctgaaactccaaacaggcttccctgggcagagacattctgtccatgctctgtggcttgctgctcgagagggatagatcacatcctgtgtggcttcttcttaaatgaagaaggacattggaagcctgtgctgggcttctctggaccccccgatgtatatgtatgtatattaaagagagaccagggtctcactctgttggccaggctggtcttgaactgctagcctcaagaaatcctcccgctttggcctcccaaagtgctgggattacaggcatgagtcaccatgcctgatgtatatatttttccagctcccttcttttctgtatcatttgctattactacctcttagctattagtataaactgatcttgagttgtgtaaatctttctggtgattcactgtgatgggatgattgtgtcctctcaaaattcctatgttggagtcctgacccatggtacctcagaaagtgactgtatttgaagataggtctttaaagaggtcattgtaaattaattaataaggtcattagggtggactctaatccgatatgactggtatccttataagaaaaggaaattagcacacagacacacaatcagagggagaagacagccagtcatctacaagccgaggagacagacctcagaagaaaccaaccctgcctgcaccttgatcttggacttctagtcgccagaactgtgagaaaacaaatctcatgtttaagccagaacctagcacgtggtacttgttaaggcatccctagaaaactaatacactcactgaatgaggcaggtagctgtttcttttattttttgagacagagtctcactttgtctccaaggccagagtgcagtggagcgatcacagctcactgcagcccctgccttccaggctcaagccatcctcccacctcagcttctcaagtagctgggactacaggcatgcaccaccacgcccagctaatttttgtattttttttttttttttgtagagacggggttcaccgtgttgcctaggctggtctcaaacccctgagctcaagcaatctgccctccttggcctcccaaagtgttggatttacaggcgtgagccactgtgcctggatatggtaactttttcatatgctatttgcttgatgattatttttctgtttctgatataatgctttttattagagagttatctgtttgtttttattttttaatgtttgaatttaaaaaattagtataatttgcataattgaaaaattatatttgaataattgaaatatatttgtataaccttaaatttaaaaactatgatagcgtatacagtgaaattttcctctcatcccttttttccatttaaccagtgcacttcccaacagccaacagataattttagtttcctcactccctgagctattttatgtatatgcaagtagatatgtacatacatatttctgccttgtaacacaaatagtagcatactatacaactgctctgcttcttcctttttttagctaagaatattaaaagagtgaaaaagatgtacgctaacaaaaatcaaaagaaaactagagtgacattataagaactgatgatgtagatttcagagcaatgattactgctaggaaaaaagggtcattttacattgatcaaagaggtcaactcatcaggaagacataataatcctaaacacttatgtacttaacagagcatcaaaatacatgaagcataaatgaaagaaccgtgggagaaagtagacaaattaatgactgtagttgaagatttcagtatccctctatgaaaatcagggtagtacaagtacacagaaaattggtaaagatatatgacttgaacaacattatcaaccaaattgacctcatttacatttgtggaatgttccaactaagaacgtcagaaaacatactcttttcaagtgcacatggaacatttaccaagatagacaatattttgggtcaccgcaagtctcaacacattgaaaggattcagatcatataaagtatgctccatgaccatgatggaattgaattagaaaccaataatgtatctctggaaaatacacaaatatttggaaattaatatgccttctaaaaaatttatgcatcaagaagaaatcaaaagggatatttgaaagtactatgaactgatggccaggcatggtggctcacgcctgtaatcccagcactttgggaggccgagaaagatggatgaagtcaggagttcaagaccagcctgggcaacatggcagaaccccgtctctactaaaaatacaaaaaattagccgggcgtggtggtgggcgcctgtaatcccagctactcaggaggctgaggcatgagaatcgcttgaagctgggaggtggaggttgcagtgagccaagatcacgccactgcactccagcctgggcaacaagagtgaaactcggacaaagaaagaaagaaaagaaagagagagagaaggaaggaaggaaggaaggaaggaaggaaggagggagggagggaaggagggaaggaaggaaggaaggaaagaaggaaggagggagggagggaaacaaaaaagaaaaagaaagagaaaaagggaggaaagaaagaaaagaaagaaagaaaaagaaagaaagaaaagaaagaaactaactcaccatttagtaaccatagtagtaataactgatttgggcaagagtcatcaatgggtgaaagcttgatgaggaataggatacttatatacccccaaacaaagccacaaattattaataacaaaggggaaagtagtaattttacaatggcaagacaccactgtaaacggataatgaaagaacatcaacaataatgggaaaaaaatgatgcaatttacctcctgctatgctgctctgagaacaagcataatttctgtggtagtcctccaaaaatgcataacctgagtctgttcgtggggaggcatcagataaacccaaattgagggacattgtacaaaacaactggcctatatgcatcaaaaatgccaatgtcacaaagtctggggaactctccccagttcaggagacaattaaatgtaatgtgtgatcctggactgtgaaaaaagtaactataaaggatggtattgaaacagttgtcaagattggagtatagtagtaacaaatcaaggctaaattttcttattgtactgtcgtgtgtaaaagaatgtctttgttagaaaatacacactgaaatatccacaggtgaaggagaacaatagctccaatttacaaatgcttctgaaaaaatatatatatacacacacacatacagagagaaggcaagtgataaagcaagtggggcaagtttttttaaactggtgaatctgggtaaaggatattcaggaattctttgtactattgttgcaacatttctgtaagtttgaaatttaaagtttaaaaagaaagagaggccggactcagtggctcacgcctgtaatgccagcactttgggaggccgaggcgggcggatcacgaggtcaggagatcgagaccatcctggctaacacggtgaaaccccgtctgtactaaaaatacaaaaaattagccgggcgtggtggcgggcgcctgtagtctcagctactcgggaggctgaggcaggagaatggtgtgaacccgggaggcggagcttgcggtgagccgagatcgtgtcactgcactccagcctgggcgacagagcgagactccatctcaaaaaaaaaaaaaaaaggagagagaaggcataaacaatattaaaaataaaacagaacattactatagacgtagtagagattttaacgatcatgaagaaaatactagaaataagtctttatgttttattttattttattttatttattattattattttttgagatggagtctcattctgtagcccaggatggagtgcaacggcgcgatctctgctcactacaacctccgcctcccaggctcaagctattctcctgcctcagcctcccaagtagctgggattacagaaaagcgccaccacgcccaactaatttttgtatttttagtagagatggggtttcaccatgttggccaggcttatcttgaactcctgacttcaggtgatccacctgccttggcctcccaaagtgctgggattacaggcgtaagacaccgcgccaagccctttatcttttagatgtatatactgagatacttatcataaaatggtgggatatctgggatttccttgaagataatccagggcgccaggtatggtggctcacacctgtaatcccagcactttgggaggccaaggccggaggatcacttcagctcaggagttcaagatcagcctgggcaacatggggaaaccctgtctctattaaaaatacaaaaagtagctaggtgcggcggtagcacatgcctgtagttccagctacttgggaggctgagttgggaggatcacttaagcctaggaggtagagatcagcttcagcaacatggcaaaaccccatctctacaaaatatacaaaaattagctggacttggtggtgcacacctatagtcctagctacttgggaggctgaggtgggaggattacttgagcccaggaggtagaggtttcagtgaaccgagatcgtgtgactgcactccatcctggatgacagagtgagaccctgtctcaaaaaaaaaaacaaaactgcactcttttatgtatttttatacttttgaaatgttctataatatttttgaaatgttctataataagagaatattgtgaagactttatagaaatacatttgagaacctaaatagagtaaattactagaatcaaactaaggaaaaaatggaaaatctgaaaaaaatgcaataatcattaaagagattgaattgtcatttgaaagtctgtcctcacaaaagacctccttcctctactgtggtcagcatctttggcatacatgagataaaatgtatggtccagtccagcctctaagcctgtgcaattcattcagtcattcagcaaatatctattgaatactacgtatgggccaggcactcttctggctaccggggatacataagtgaacaacaacaacaacaacaacaacaaaggaaaaatgtctctaattttgtggcacttaatatacaacaaataataatgaataagtgatatatagtatgttaggaggagaacattactatggaaaaatagaggaggataaaggagactgagaggcagaaggatgggccagtttgtaatttgaaaggcaaggttgtaggcaaggttcagattggaacactgaaacacggatttcccacagaaatgaacaggtctccttggagagatggctaattcaaggtctgggtcaagaagtgtacaggaagagcctggaacattttgttgcaccaaaaagataaaacagaacaaaacaaaactcggttaattagttactgttggaagatgctagcaagccagttctttagtgatttttaaaagacagataattataaggaaactttttaataaacaagcatttatactgttttcgacacagactaccactgactactcaaataatacatgaggggatatttctttttatggaagtattctggctaataagaagaatagaattaatcaccagtggctgccagcaccacaaaaagagatacaactagatcttatgtgttttacaatttttttatatttggggggctggtctcttatatgtctcttttggagaaacagcccaccacctggattcatctcctagggcttccataacaaagtaccataaaatgagtgtcttaaaacaacacatggccgggcacagtggctcatgcctataatcccagcactttgggaggccgaggcgggcagatcacttgaggttaggagtttgagaccagcctggccaacaaggtgaaaccccgtgtctactaaaaatacaaaaattagccagacatggtggcgggcacctgtaatcccagctactcaggaggctgaggcaggagaatcgcttgaacctgggaggctgaggttgcagtgaggtgagatctcgccattgcactccagccttggcaacagagcgagactccatctcaaaaacaaacaaacaacaacaacaacaaaacactcacgtttattctctcaaagttctggaggctaaaactctgaaatcaaggtgtcaatagagctgtgctccctccaaaggctttaggggaggatccttccttgcttcctcctagattctggtggtttctggcaagctttgatattctttggcttatgactgcataattacaacctctacctccatattcatgtggccatcttccctctatgggtgtctgtgtccaaatttccctcttatggacaccagtcatattggattaggcttcccctaatccagtatgacctcatcttaacttgattacatctacaaaggccctatttccaaataaggtcacattcacagattccaggtagacatgaaatttgggtaacactatttaacccagtataccacctatgaagtattctttttatttttctcctcagcttttattttaagttctggggtacatgtttaggacgtgcagtttgttacataagtaaacgtgccatggtggtttgctgcacagatcaacccatcacctaggtattaagcccagcatccattagctatttttttctgatgctctcccaccacccgccccgcccccgacaggccccagtgtgtgttgttcccctccctgtgtccatgtgttctcattgttcagctcccacctataagtgagaacatgcagtgtttggttttctgttcctgcatttgtttgctgaggataacagcttccagctccatccatgtccctgcaaaggacatgatcttcttcttcttttttatggctgcatagtattctgaagtattcttgacaaaaagaaaaaatcaacctgaatctattcaagcctctagagtcaactaaaaatttacagaaaatacaggagactgagtaacgtgttaaatgacatcacagggatgcaattagccaactccagactatgggaaactctacaggacaaactacctggtatcttcaacaaataaattgcagggaataaagacatgatggaggaacctagactaaaagagacttaaagatgaaccagtagctatgtttggacctcatttggatcccaattcaaacaaactttaaaatacacacccatttatgacacttatgagacaattggagatttgaacactgacttgaatatccattgatattaaggaattatttttgaaaatgcggaataatactaaggctatggttttttttagagagtccttatcttttagaaacatatactaaatttgcagataaaaatgacttgatgttggggatttgtttcaaaataatatgggagttgggggatgtgggtgcagatatggctgtgacaagatggttcatgggctgataattgttgaagctgggtgatgggtacatgtgggagttcatgatactatatttttatgtgtttcaatctttccataataaaatttttttttagaaaaaagaaagaaaggaaagaaggaaagaaag
